United States Patent Application Publication US 2006/0228715 A1 - sequence listing, part 4

SEQ ID NO: 17065 - DNA, 201 bp, Homo sapiens
taggttctttcttgcctatctagacttgagcagactccagaagaataaagccaataatttctaggaattcaatcttgtaaacttctgggtcaggtaaagayagcaggttgcttttgatagtttttggcctcatttgaattctaagcttatgaaaacactgtagttgtgaaatactttagcatgaagccgaggctggtgaag

SEQ ID NO: 17066 - DNA, 201 bp, Homo sapiens
aacccccatgacacaagtttacctatgtaacaaacctgcacatatatccctgaacttaaaatcttaaaataaaagttaaaaaaagaaacctctttctgtaktaggtttgaatgcctaatacacacattttctctctcctgccttttaaaacttcatgcttatgctttccccatatgtttcaagcatgatcttgtgtcatct

SEQ ID NO: 17067 - DNA, 201 bp, Homo sapiens
acaaaacaaatttataaactttcttaaaacattatgaaatttttttgtgattttttttttttttttgcttatcagcaatcgttagtgttagtgtattgtaygtgtggctcaagacagttctctttttccagtgtggaccagggaagccaaaagattggacacccctgccgtagacatttctgcaagtgaaatagttgggat

SEQ ID NO: 17068 - DNA, 201 bp, Homo sapiens
accattataaatatgattgcaaattataaataaaatattaaaaaaattgtcttgccaaatttctgattatagttgaaagcagacatgccgtggcagacaayagatataaaaaacaaagatgaaaacatttcagtggtgtactcatgctgtcagagtttaaaacgtatatttataaatatatgcagtgtgtctctgtgtgga

SEQ ID NO: 17069 - DNA, 201 bp, Homo sapiens
ctcctgcctacagccttctttttttctgggcgagggaagagtatcttagtgaactgcgtcccagagagggaaattgatagtgatgtccacaacccacagtvttctgcctttgtgaatccccttcacatatgcagtccatcctaggagatgctatgtgacctgggacatcccttgatgccagcacatgctgtattatctttg

SEQ ID NO: 17070 - DNA, 201 bp, Homo sapiens
gtttaaacccctgtgaatctcaaaatatcaataaatgaaaggacacgtaactgtcaattctgagtttcccaactggatcagttgtgacttttatttctttygcacctgcctgtctcatcttttttttttttttaattgtatccaaatacagacagcaggtttctgaaaggatctcactctgttgcccaggctggagtgcag

SEQ ID NO: 17071 - DNA, 201 bp, Homo sapiens
gtttttttgtggttcagagtgagtatctgaaattccatatttagcctccaaataataattttataaactgggcttattttatagtcttgaaagtacaagcsttgctttttctgcagtgataacgttcatgaagggaaaagaaaactgcaaaatcaggaaaagtcatttaatttttaaaaagtttaggaaattctgtgcttt

SEQ ID NO: 17072 - DNA, 201 bp, Homo sapiens
tcaaattttatatatggaagggaggtgggaactattcagtcttggaagaataaagtttaaacccctgtgaatctcaaaatatcaataaatgaaaggacacstaactgtcaattctgagtttcccaactggatcagttgtgacttttatttctttcgcacctgcctgtctcatcttttttttttttttaattgtatccaaat

SEQ ID NO: 17073 - DNA, 201 bp, Homo sapiens
gcattttgaactacctctggcttccctctacagttctaggaagatgcagctaacttagctaattttcaaggcacgagaaggtgctagaaacatgacctccmagctactgtttatatatcaaggggtttatttcttcagtatcttaacttccaaaacaatagtttggatagtgtttcaatgctaatgtgacatgagcagaca

SEQ ID NO: 17074 - DNA, 201 bp, Homo sapiens
acttcatctcaaaaaaaaaaaaaaaaattaaaattgtgcaactcttctaagttttgtgatttggaaaatatagtaaattttcattaagatgttgtttgtgytaacctttaatgtgtttattgtcgttttaaaactaataaatatttaaacattctcaatgtaattttctaatattagaaatatcagtacacacaatccaca

SEQ ID NO: 17075 - DNA, 201 bp, Homo sapiens
tgccaaaaccttctggaacatgctgaatatcatggtatgaagaaaatatttagtaaaattgctaagcaaggggtttagagctaacaccctaatcacttgtktctcacccagatggtgtcccagatccaatataaattttctaccaggacgtaaaaaaagcaaacctttaaccagccatgcgttttgtttgaagtctcaggg

SEQ ID NO: 17076 - DNA, 201 bp, Homo sapiens
aatactttctatttttccttggtcataaccattgttgacaactgtcatagctatccttctgtacatatgcttggaattaattgttgtacctgtttaacctrtgcccacatgatatcttatttgccatttcctttcatccctgggattataaccataccctggggattgtgatccaagaacaacttaatggaaattgtaaga

SEQ ID NO: 17077 - DNA, 201 bp, Homo sapiens
gcaggtggattacttgaggcaaggagttcgagaccagcctggccaacatggtgaaatcccgtctatacaaaaaatacaaaaattagcccagtctggtggcrcatgcttgtaactccagctacttgggaggctgaggtgggaggatcacttgaatgggggacgcggaggttgcagtgagctgagatcatgccaccgtactcc

SEQ ID NO: 17078 - DNA, 201 bp, Homo sapiens
aggccgaggcaggtggattacttgaggcaaggagttcgagaccagcctggccaacatggtgaaatcccgtctatacaaaaaatacaaaaattagcccagtstggtggcgcatgcttgtaactccagctacttgggaggctgaggtgggaggatcacttgaatgggggacgcggaggttgcagtgagctgagatcatgccac

SEQ ID NO: 17079 - DNA, 201 bp, Homo sapiens
aaccctcaagaattaggcatgaaggaacataccacaaaacaataagagttgtctatgacaaacccacagccagtactgaatggatgaaagctggaagcatytcccttaagacctggaacaagatgaggatgtctagttttgctgcatagtaccggaagtcctagctacagcaatcaggcaagagaaagaaataagaagcat

SEQ ID NO: 17080 - DNA, 201 bp, Homo sapiens
aaaaaccagtggcttgcaaagggtggcaatcaggctaccaaaaggttacatggggcaaaactcctgtgtgtgagaaaaatggggttggggggagtgggtasgcaacttaagtcaaaacattggtgacccagagagaaaaggaagagcaaaatgtaaggtgtgggtggaggaaatacatgttcaggttcaactgtagagagg

SEQ ID NO: 17081 - DNA, 201 bp, Homo sapiens
tctcttgggtggttcctcaacgtgtgtgaccttgaccaagtattgtcctcacttcttccatctgtgaagatgaaagcaactcttaatacttagaatcattkctgaggccttggtgtcagttggttcactttctgatggtcaaagttacggaataactccttttctcaccacaaagttgcagcattttaataaggaacaggc

SEQ ID NO: 17082 - DNA, 201 bp, Homo sapiens
acaaagatgatctcactccttcatttcatcagtcccatgaggcggggatgattatcaacatcttattgatgaagaaacaagctccaagaggtaatgtggcyaacgtcttaaacttgaagttgaagagcaagaatctgagccctgttttagatttttaatctctgtgtaaacttcttccttttgttccatcttttctcttta

SEQ ID NO: 17083 - DNA, 201 bp, Homo sapiens
taagctgcccacggacaccaactgtcttgttttgtccccattgtaaacacaagtgccccagaagtgcatgtgctgaagttggcctctgttgaatgaatgcrtttaaatgtggaagtttttgtattattataggataagaaatgttgcaattgcaaaaatgttggggactagagccatctctgggaggttttcctaggacgt

SEQ ID NO: 17084 - DNA, 201 bp, Homo sapiens
gttgctgggaagggggtggggagaggctgtcgcagaggaagactaaacagtgacgagttaatgggtgcagcacaccaacatggcacatgtatacatatgtracaaacctgcacattgtgcccatgtaccctagaacttaaactattattaaaaaaaaaaaaccagtggcttgcaaagggtggcaatcaggctaccaaaagg

SEQ ID NO: 17085 - DNA, 201 bp, Homo sapiens
aaaggtagaatctgttttcccaccatttaaatttgggctgatctgctttagtttttagtatggggtagaagggccaatgagccggtcaagcccaggcttcygcaggaggctgaattccaccatgacccttactcttgtgtaatctccttgccttcactgtggttggcacttgtgaatatgatgagctattactcttgtcat

SEQ ID NO: 17086 - DNA, 201 bp, Homo sapiens
gtcaggctggtcttgaactcccgacctcaggtcatccgcctgcctctgcttcccagagtgctgggattacaggcgtgagccaccgtgcccggcctatggawgcctttcttcccaggaataaccagcacaggagccaggtcattgtcctttgctaataagtgaatataatcattattttttaaatggaaacaactctctcaa

SEQ ID NO: 17087 - DNA, 201 bp, Homo sapiens
cttaactgagatatgagagcagtgaagtgatgtatgtagagaaaggcacagttctccagagctcttgagaatccttaaaataaatatatgttccttacaarttttcatcgtaagcttggtgcacatttctaaggcagctggggaatcatagagcagctcatcttttcttcttctttttttttttaacagtctatggactaa

SEQ ID NO: 17088 - DNA, 201 bp, Homo sapiens
gggcagaggccacttcactttatcctaagtgcagtgggaaccaatgcagggctttaagctggggagagacatgagcttctgtgctgttaatagagtggcgsagtaagggtgaatgtttgctctcgctgtcctcccggtgagagatgatggtggctgtgactgggtgatggcatgagcaatggagaaaagtggaggaatctg

SEQ ID NO: 17089 - DNA, 201 bp, Homo sapiens
ctgccaatcagcaatggacacctcccagagttctggcagacctggcttgtgaagttaagcagggcttggtgaatttagctcacttaactgagatatgagarcagtgaagtgatgtatgtagagaaaggcacagttctccagagctcttgagaatccttaaaataaatatatgttccttacaaattttcatcgtaagcttgg

SEQ ID NO: 17090 - DNA, 201 bp, Homo sapiens
ataataacagacagaaaaggaaaagcgcagaaggttacaaacttccaatagggagacctggtttggttcccagggacagggaaggttccctgagaaagtgmtactaggctaggatgcaaaggaggaatgggagttaaatgagtaaagaaggaggggcctggggaaagagcatcctagcaagaggaactgtacatgcaaagc

SEQ ID NO: 17091 - DNA, 201 bp, Homo sapiens
acttgaattaaattgttcctatcagccccctcctctagatcaacaggttctaaaacattttttgcctcttctctatcactaaacattgtgagcacaccctytaattgaagttgggctccccaactgttctagcagcccaaactgaaaaagacatcctctcacatcaggcagtggttgagggctgttctgaggaaccatgac

SEQ ID NO: 17092 - DNA, 201 bp, Homo sapiens
tacctgaggcaaggtaacatataattgaaataatttcttcacacacttatttcttaagcccctgctatgtgccatcttcacagagttcatggtctaaagamggaggtagacagtcacatgggtccgtaggtagataataacagacagaaaaggaaaagcgcagaaggttacaaacttccaatagggagacctggtttggtt

SEQ ID NO: 17093 - DNA, 201 bp, Homo sapiens
cctcttttctgccatgtaaggacaagtgaaaaaatggaagtctgcaagacggaagagggctctcaccagagctcgaaaatatgggcaccctgatcttgtaytttcagcctccagaagtgtgagaaataaatgtttgttgtttaagctaccctcgctaggatatcctctaaacacttctgccgagatgaatcctattaattc

SEQ ID NO: 17094 - DNA, 201 bp, Homo sapiens
aggaactgtacatgcaaagcccccagttggggatcacaggttttcctggggaactaaaggttggccattgtggctggagcatcaagaatgagtgagggagkcctgagagtcaacgcggaataggtgggcagaggccacttcactttatcctaagtgcagtgggaaccaatgcagggctttaagctggggagagacatgagc

SEQ ID NO: 17095 - DNA, 201 bp, Homo sapiens
ctagcaagaggaactgtacatgcaaagcccccagttggggatcacaggttttcctggggaactaaaggttggccattgtggctggagcatcaagaatgagygagggaggcctgagagtcaacgcggaataggtgggcagaggccacttcactttatcctaagtgcagtgggaaccaatgcagggctttaagctggggagag

SEQ ID NO: 17096 - DNA, 201 bp, Homo sapiens
aagagtctctcagcctgagttttcttagctatatatgcgtatataatgtgcatagaatgcatatgtacatattggccatataaaatgatgaaccatatacstgaggcaaggtaacatataattgaaataatttcttcacacacttatttcttaagcccctgctatgtgccatcttcacagagttcatggtctaaagaagga

SEQ ID NO: 17097 - DNA, 201 bp, Homo sapiens
taagagtctctcagcctgagttttcttagctatatatgcgtatataatgtgcatagaatgcatatgtacatattggccatataaaatgatgaaccatatayctgaggcaaggtaacatataattgaaataatttcttcacacacttatttcttaagcccctgctatgtgccatcttcacagagttcatggtctaaagaagg

SEQ ID NO: 17098 - DNA, 201 bp, Homo sapiens
ccatagaggtctttcgggaaaaatttcccatttctacttatgtttggaaaaccttgggtgtgtattttcactgtgtatttaaccttctttcctggcttctrgaactgtgctgtccaatatggtagacactggccatgtgttgcttttgagcacttaaaatgtggctactgtcgctgaaaaacagaattgttaattttattg

SEQ ID NO: 17099 - DNA, 201 bp, Homo sapiens
acttatgtttggaaaaccttgggtgtgtattttcactgtgtatttaaccttctttcctggcttctagaactgtgctgtccaatatggtagacactggccaygtgttgcttttgagcacttaaaatgtggctactgtcgctgaaaaacagaattgttaattttattgaattttagttaatttaaatttgaataggcacctag

SEQ ID NO: 17100 - DNA, 201 bp, Homo sapiens
aggaggtagaggttgcagtgggctgagatcatgcctctgcactccagcctgggtgacagagtgagaccctgtctcaaaaaacaaaaacaaaaacaaaaacraaaaacctgatacatgtagtgaagaagctgatctgtcaaaagccagaaagcaaatgcagaggcatactaaagtcagatgtttaggggaattcttttggaa

SEQ ID NO: 17101 - DNA, 201 bp, Homo sapiens
cataagtggaaggtgaccaaaaagatgaacatgtaaagaggggccctcatgtgtcggcaaattgttgctattctgagctctccacttgcagcaattatctractgttgttggaagaagctaagaaacaatcctccagccctcccataatgccctctccaaacaaatgaaaacacagtgcaattggcttttcagtgtttgct

SEQ ID NO: 17102 - DNA, 201 bp, Homo sapiens
ctcccttcccccaacttttttagcctaagcctctctccaccacttcctccctcattcaggatttatttatgcaattgatgggtatgacacagcatgtgctrtgtatcccatcctctgtcatttcacccatggacaggcttcttatagggagcgtgagtttttcctgctgggatggggtagagggaggcctccaatcctccc

SEQ ID NO: 17103 - DNA, 201 bp, Homo sapiens
ggcttaataacctgggtgatgaaataatctgtacaacaaacccccatgacacaagtttacctatgtaacaaacctgcacatatatccctgaacttaaaatyttaaaataaaagttaaaaaaagaaacctctttctgtagtaggtttgaatgcctaatacacacattttctctctcctgccttttaaaacttcatgcttatg

SEQ ID NO: 17104 - DNA, 201 bp, Homo sapiens
aaacctgcacatatatccctgaacttaaaatcttaaaataaaagttaaaaaaagaaacctctttctgtagtaggtttgaatgcctaatacacacattttcyctctcctgccttttaaaacttcatgcttatgctttccccatatgtttcaagcatgatcttgtgtcatcttttttggaggtaaaatgttgggttgagtggg

SEQ ID NO: 17105 - DNA, 201 bp, Homo sapiens
ctgcacatatatccctgaacttaaaatcttaaaataaaagttaaaaaaagaaacctctttctgtagtaggtttgaatgcctaatacacacattttctctcycctgccttttaaaacttcatgcttatgctttccccatatgtttcaagcatgatcttgtgtcatcttttttggaggtaaaatgttgggttgagtgggttag

SEQ ID NO: 17106 - DNA, 201 bp, Homo sapiens
gtctgctcaagccagactcatggacaaattccaggtccattattcctgatgaacaagtaacttaagagtctctcagcctgagttttcttagctatatatgygtatataatgtgcatagaatgcatatgtacatattggccatataaaatgatgaaccatatacctgaggcaaggtaacatataattgaaataatttcttca

SEQ ID NO: 17107 - DNA, 201 bp, Homo sapiens
taatcaggatggaagtcaggactatcagctggtcctctgtactgagtgtacatagagagatttagggaaaactgaccttaaagaaattaatcttaaaaagrtgtgataccactttgggaggtcaaggagggcggattgcttgaggccaagagtttgagaccagccgggccaacatgacaaaactccgcctctaccaaaaaa

SEQ ID NO: 17108 - DNA, 201 bp, Homo sapiens
aaggtctaatatccagaatatgtaaagaatttaattcaacaaacaaaaaataaataaccctattaaaaagtgggcaaaggacataaacagacacttcttamaatgaggtatacaagtggccaacaaatatatgaaacaatgctccacatcactaatcatcagtgaaatgtagatcaaaaccacaatgagataccatcttgc

SEQ ID NO: 17109 - DNA, 201 bp, Homo sapiens
catatgcagaagaatgaaactggaccactgcctatcatcatatacaaaaattaacttaagatagattaaagacttagatgtaagacctaaaactataaacrtggtagaagaaaatcaaggaaatactcttgtggacataagccttggcaaagagtttatgactaagttttcaaaagcaattgccacaaaaacaaaaattga

SEQ ID NO: 17110 - DNA, 201 bp, Homo sapiens
cagcaccctttcccccttccttgccctttatcttgtctcatccttaccttgttggaaaaacacattggcaacatcacagcccactcaaaaggttgccaacrccttctcccaataatagcgatcaacatatgtaatagacttcagctgtctttttgggagatctggcaacaaacttaactgaaaaaagtcagatttttacaa

SEQ ID NO: 17111 - DNA, 201 bp, Homo sapiens
ttggagccctgctataaaaggaagcaagctgccatgttctaaatagccctatggagaggtccacatagcaaggactcacgtctccaagctaacagccagcragaaactgaggcctcagttcaatagcctgtgaggaactaattcctgccaatagccacatgagtgagtgtggaagcaggtccttttccagtggagccttga

SEQ ID NO: 17112 - DNA, 201 bp, Homo sapiens
actgtaaggctatggtaaccaaaacagcatggtacaacttcaaaaacagatacatagatcaatagaacagaatggataacccagaaataaagcctcctgcstacaatcatctgatcttcagcaaagccaacaaaaataagcaatagggaaaggactgtctattcaatcaatggtgctgggataactagctagccatatgca

SEQ ID NO: 17113 - DNA, 201 bp, Homo sapiens
gctttaaattggctttaaattacttcagagtaattttagtacatcttaggggtgacagttttcctatgaatgaccgctgaaagtcaggggtaaattaggcktacctgaagcaatttgacttttttttaaacgcttgttcccttctgtgtccattcaaaacctacctgcatttcataaccctagtataatgggaataagttt

SEQ ID NO: 17114 - DNA, 201 bp, Homo sapiens
cagggcagtaaatagacagttaaaaggacacttgttttacagtatgtccactgaaacaagaaggcagcatgttgccttgttcaacctcagctgggaatatrtgtggcaagtgactcagacttttttcctgttctatgcaaatctgtgaatggccatgaaagcactgagagaattgattttggagttacaaataagtgaatc

SEQ ID NO: 17115 - DNA, 201 bp, Homo sapiens
ctcttgggtggttcctcaacgtgtgtgaccttgaccaagtattgtcctcacttcttccatctgtgaagatgaaagcaactcttaatacttagaatcattgytgaggccttggtgtcagttggttcactttctgatggtcaaagttacggaataactccttttctcaccacaaagttgcagcattttaataaggaacaggct

SEQ ID NO: 17116 - DNA, 201 bp, Homo sapiens
gggctcaagaagtatggagaagaggtacaagtttgtctggtgtttctccagctccagttgagtgctctcctatttcgcatgacactttcttagtttctcasggtggagcccatcaaaacctccatccaggcccttatatatgtattttttgagatggagttttgctcttgttgcccaggctggagtgcagtggcgcaatct

SEQ ID NO: 17117 - DNA, 201 bp, Homo sapiens
tttttaacagtctatggactaattaagctctgaaaacccattaaaacacaagtaggccatgatttcaacacttctaaagaaaaaaaggcagatttttgaaktctcgttttctctggctctgcctctaaagcctcaaaaacattttataataagtggataaaactccactgagggattgggcgtggtggctcatgactgtaa

SEQ ID NO: 17118 - DNA, 201 bp, Homo sapiens
tcttttaaatctccccagctgctcaaattttatatatggtagggaagaacttgacataccctgactgtcttggagatggagggagctttgtgataaggaaygtgggtcatctttagtggctgaaagtggcctctcactaacagcctgcaaggaatcagggacctcagtcctacaaccacaagtaactgaattctgctgaca

SEQ ID NO: 17119 - DNA, 201 bp, Homo sapiens
tagaaactatttgtcctctatccttccctcctttccaggcagctgcctgggcattaggttttactaacttctcctgaggatgatgtaaccaaaccaaagarttgattcttagtttttgggtttcaaacgcttgggctttgaatttcataaggcaaaactaagaaagactttgggaccatacaattattccaaagccactga

SEQ ID NO: 17120 - DNA, 201 bp, Homo sapiens
tctcttttaacttctgagtttatggggagcctcttttaaatctccccagctactcaaattttatatatggaagggaggtgggaactattcagtcttggaaraataaagtttaaacccctgtgaatctcaaaatatcaataaatgaaaggacacgtaactgtcaattctgagtttcccaactggatcagttgtgacttttat

SEQ ID NO: 17121 - DNA, 201 bp, Homo sapiens
taattgtcttctataaagtcactgtaaacactgaattagcaaatactgaaccattgctcctaggggaaatacagggttatgctcccaggagcctctggtcrcagtatgttcactatctgatcatcacataccttatgtgtgtttctatttaaaatcaccttatttactgtctattgttggattgttagtattgaactcatg

SEQ ID NO: 17122 - DNA, 201 bp, Homo sapiens
tttcctgttctatgcaaatctgtgaatggccatgaaagcactgagagaattgattttggagttacaaataagtgaatctctgaataatgagaataagctgrgttgcttttcgtcaacacttgcatgttaagagatgctttccgtgtatttgggtgggcagctgagaagctactgggttccttcaaaccctgtcacttggat

SEQ ID NO: 17123 - DNA, 201 bp, Homo sapiens
gtgacacgatatcaactcaaagcaacctctgcctcccaggtgcaggcgattcttctgccacagcctcctgagtagctgggattacaggcatgcgccaccaygcccagctaatttttctatttttagtacagaccaacaggtggggtttcaccatgttggccaggctggcctcgaactcctgacttcaggttgatctgccta

SEQ ID NO: 17124 - DNA, 201 bp, Homo sapiens
atagactatgcatcctacaaaggtctaatatccagaatatgtaaagaatttaattcaacaaacaaaaaataaataaccctattaaaaagtgggcaaaggamataaacagacacttcttaaaatgaggtatacaagtggccaacaaatatatgaaacaatgctccacatcactaatcatcagtgaaatgtagatcaaaacca

SEQ ID NO: 17125 - DNA, 201 bp, Homo sapiens
tttctgaaaggatctcactctgttgcccaggctggagtgcagtgacacgatatcaactcaaagcaacctctgcctcccaggtgcaggcgattcttctgccwcagcctcctgagtagctgggattacaggcatgcgccaccatgcccagctaatttttctatttttagtacagaccaacaggtggggtttcaccatgttggc

SEQ ID NO: 17126 - DNA, 201 bp, Homo sapiens
ttcccccagaagcagatcctgagatatggatttgagtgtaagtaatctgttttgggagatgatcccaggaagtgcttttgagggagtggggaattatcaascagatcatggtggtgggcaaccagggatcctttctgctgggacctctcagaggctgtgtagaacatgcctcatagttgtgcaactgaaggcaaagatgct

SEQ ID NO: 17127 - DNA, 201 bp, Homo sapiens
agcaggtttctgaaaggatctcactctgttgcccaggctggagtgcagtgacacgatatcaactcaaagcaacctctgcctcccaggtgcaggcgattctyctgccacagcctcctgagtagctgggattacaggcatgcgccaccatgcccagctaatttttctatttttagtacagaccaacaggtggggtttcaccat

SEQ ID NO: 17128 - DNA, 201 bp, Homo sapiens
gcagatcctgagatatggatttgagtgtaagtaatctgttttgggagatgatcccaggaagtgcttttgagggagtggggaattatcaagcagatcatggyggtgggcaaccagggatcctttctgctgggacctctcagaggctgtgtagaacatgcctcatagttgtgcaactgaaggcaaagatgctggggagattgt

SEQ ID NO: 17129 - DNA, 201 bp, Homo sapiens
tttgggagatgatcccaggaagtgcttttgagggagtggggaattatcaagcagatcatggtggtgggcaaccagggatcctttctgctgggacctctcaraggctgtgtagaacatgcctcatagttgtgcaactgaaggcaaagatgctggggagattgtcctctgctatggactcaaagtttgtgtccttccaatatt

SEQ ID NO: 17130 - DNA, 201 bp, Homo sapiens
tcattctaccaaaaacacatgcacttatatgtttatcacagcactattaatatgagtaaagacattgattcaacctaggtgcccttcagtggtggattggrtaaagaaaatgtggtacatatacaccatggaatgttacaaagctataaaaaagaatgaagtcacattgattgcagcagtgtggatggagctagaggtcat

SEQ ID NO: 17131 - DNA, 201 bp, Homo sapiens
taccttttgtgatttcaaagactttgcaatggacagaatgtttgtgtgccttcaaaattcatgagttgaaatcctaatccccagtgtgatggtattaggasaatgaaggcctttgggtggcgattaggtcactagggtggagccctcataagtgggattagtgcccttatagaagggaccccaaagaactccccagctctt

SEQ ID NO: 17132 - DNA, 201 bp, Homo sapiens
aggcctttgggtggcgattaggtcactagggtggagccctcataagtgggattagtgcccttatagaagggaccccaaagaactccccagctcttttcacyatgtgaggatagaacaagttgatgacagtctgcaacctggaagaaggccctcaccaggaccagaccatactgtcaccctgacttccagcctccaggatac

SEQ ID NO: 17133 - DNA, 201 bp, Homo sapiens
tgatctgtgccaaacaggaaaatactgtggttcagcaatagaaaatgaagagggaggaaatgtttcaggtcatcaaatggggtcagaaatacgcatgtcartgtacttttgctgctctcgcgaatttctcaaaagggtatctgtgaatacctaatttaggtttttttggtttcattttaagtacacatgagcttctggaaa

SEQ ID NO: 17134 - DNA, 201 bp, Homo sapiens
aaattggatatttatagattctagctccattacatagtatctatgtgaccttgggttactcaagctctataagcttcaagttctttatatgtaaattgagyatcataatataaacagggtattgtgagaattagcgggttctcattacttactactaatgctcctttcgatttgaaaagatctgctccttccctcttctcc

SEQ ID NO: 17135 - DNA, 201 bp, Homo sapiens
tttctctggctctgcctctaaagcctcaaaaacattttataataagtggataaaactccactgagggattgggcgtggtggctcatgactgtaatcccagwactttgggaggctgaggtgggcagatcacttgaggccaggagttcaagaccactctggccaatatggtgaaaccccatctctactaaaaatacaaaactt

SEQ ID NO: 17136 - DNA, 201 bp, Homo sapiens
gacgtaagctctgttgtttcggagttcagggagtggggcagtgacctgcataaagagcccccagggagaaggcccagggtcctggcttctccgtgggactrtttcccgggtcacagaaagggagacccaagtgtcagagatgggcagattgaactgtccctgccggtgtttacaagagacacttgaccttgatggaaagca

SEQ ID NO: 17137 - DNA, 201 bp, Homo sapiens
ttctctggctctgcctctaaagcctcaaaaacattttataataagtggataaaactccactgagggattgggcgtggtggctcatgactgtaatcccagawctttgggaggctgaggtgggcagatcacttgaggccaggagttcaagaccactctggccaatatggtgaaaccccatctctactaaaaatacaaaactta

SEQ ID NO: 17138 - DNA, 201 bp, Homo sapiens
tttcctaggacgtaagctctgttgtttcggagttcagggagtggggcagtgacctgcataaagagcccccagggagaaggcccagggtcctggcttctccrtgggactgtttcccgggtcacagaaagggagacccaagtgtcagagatgggcagattgaactgtccctgccggtgtttacaagagacacttgaccttgat

SEQ ID NO: 17139 - DNA, 201 bp, Homo sapiens
ctctaaagcctcaaaaacattttataataagtggataaaactccactgagggattgggcgtggtggctcatgactgtaatcccagaactttgggaggctgrggtgggcagatcacttgaggccaggagttcaagaccactctggccaatatggtgaaaccccatctctactaaaaatacaaaacttacctcggtggggtgg

SEQ ID NO: 17140 - DNA, 201 bp, Homo sapiens
aactatgagctagtaaatgagtgttgtgttaaggtgctaagtttgtagaaattgttatgcagcaacagaaaaccaacatagccccaaaagacctcatacamttctattctctctcttggaaccttggcaagatcaagaagccatgcccagactagccttctggggaatgagagatcaatgaagcagtgccgaggagccccc

SEQ ID NO: 17141 - DNA, 201 bp, Homo sapiens
aagaatcgcttaaactctggaagcagaggcttcagtgagctgagattgtaccactgcactccagcttgggtgacaaagtgagaccctgactcaaaaaccamccaattaaccaaccaaccaaccaaccaaccaacaaacttcactgaggacagaaaatctgcctcctcaaccccaatcattttgtatttactgggacccttg

SEQ ID NO: 17142 - DNA, 201 bp, Homo sapiens
cccaaagcttcagtgttcctggccatgtttaaagcatggtctgggaatggacactgtatgaatagcccctcaccaggagtcacagctccctggagggtggrgagtgggcactgcttgatcccttctgtagggaaagagggagagatctgtgtcctggcagcttgagaagattaaaatgtactgtcttcagtttcttccctt

SEQ ID NO: 17143 - DNA, 201 bp, Homo sapiens
agtcttggaagaataaagtttaaacccctgtgaatctcaaaatatcaataaatgaaaggacacgtaactgtcaattctgagtttcccaactggatcagttktgacttttatttctttcgcacctgcctgtctcatcttttttttttttttaattgtatccaaatacagacagcaggtttctgaaaggatctcactctgttg

SEQ ID NO: 17144 - DNA, 201 bp, Homo sapiens
gcagtcctctctttcttgctgtcttggagccctgctataaaaggaagcaagctgccatgttctaaatagccctatggagaggtccacatagcaaggactcwcgtctccaagctaacagccagcaagaaactgaggcctcagttcaatagcctgtgaggaactaattcctgccaatagccacatgagtgagtgtggaagcag

SEQ ID NO: 17145 - DNA, 201 bp, Homo sapiens
aagctgccatgttctaaatagccctatggagaggtccacatagcaaggactcacgtctccaagctaacagccagcaagaaactgaggcctcagttcaatarcctgtgaggaactaattcctgccaatagccacatgagtgagtgtggaagcaggtccttttccagtggagccttgaggtggccacagcctggccaacacct

SEQ ID NO: 17146 - DNA, 201 bp, Homo sapiens
cagtaaatagacagttaaaaggacacttgttttacagtatgtccactgaaacaagaaggcagcatgttgccttgttcaacctcagctgggaatatatgtgkcaagtgactcagacttttttcctgttctatgcaaatctgtgaatggccatgaaagcactgagagaattgattttggagttacaaataagtgaatctctga

SEQ ID NO: 17147 - DNA, 201 bp, Homo sapiens
cagtggagccttgaggtggccacagcctggccaacaccttgattatagcctggtgagaggccctgagccagagaagccatgccgtacccagatccctgatycatagaaattgtgagaaatgtgtgtgtgtgtgtgtgtgtgtgtgtgtgtgtctgtgtgtgtttgagacaaggtttgcccaggctggagtgcagtggtgtg

SEQ ID NO: 17148 - DNA, 201 bp, Homo sapiens
tggagcccatcaaaacctccatccaggcccttatatatgtattttttgagatggagttttgctcttgttgcccaggctggagtgcagtggcgcaatctcgkctcactgcaacatccacctcccaggttcaagcagttctcctgcctcagcctcctgagttgctgggattacaggcgcccgccaccatgcccagctaatttt

SEQ ID NO: 17149 - DNA, 201 bp, Homo sapiens
aataaagcccttggaaactctgtgatatgccaagatccccagggtaataagtaacagagagacttcgaatgcaggttttctgagtcccaggctggtgatgyggttcagcaacacctgctactaatccaggcttccctgtgtagcagaggagttgtctccatgcaagtgtgcagtgacatgtagactaattgttctcagtgt

SEQ ID NO: 17150 - DNA, 201 bp, Homo sapiens
tttggaataactaatttttcatcaaacaggtttttcttcttatgaaatttgctggcgctctgttattataatcaggaactataaggaacccaaatgtagcrtctggttaaaaaacaaacaaacaaacaaacaagcagttaagttttatttgtaagagcaaataaaaatcatgttctattatggagttaataggaaataagc

SEQ ID NO: 17151 - DNA, 201 bp, Homo sapiens
cacttcaaagatgtctacatcctaattcttggaatgtgtgaatatgttgccttacaaggcaaaaatgactttgaagatgtgatattaaagactttaagatktagaaattatcttggattatccaagtgggctcaagctaatcttaagagcagacaacctttcccattgtgatcagagaaaggaagatggaattacagaatg

SEQ ID NO: 17152 - DNA, 201 bp, Homo sapiens
acttcaaagatgtctacatcctaattcttggaatgtgtgaatatgttgccttacaaggcaaaaatgactttgaagatgtgatattaaagactttaagattyagaaattatcttggattatccaagtgggctcaagctaatcttaagagcagacaacctttcccattgtgatcagagaaaggaagatggaattacagaatgg

SEQ ID NO: 17153 - DNA, 201 bp, Homo sapiens
aaagcctatagatgtcaacctaataatgtgctagggggtacaatgtcttttgaaattattttagggaatagatgagtaaaaatagacaaattgaagaccarattataaaaatcatccagaattatttaaaagcaagacttgaaatgagattgagaatctggactgcggatggcagagagcattgcttctgacagtaactgg

SEQ ID NO: 17154 - DNA, 201 bp, Homo sapiens
tggaattacagaatggtcagagaattgcatttctctgcatttttgttgcatttggctttgaagatgggggagggagtcatgagtcatggaatgtggaaagyctctggaagctggaaaaggcgagaacgttgatttacccttagagtctccagaaaggaacacagtcctgcagacaccttgattttggcccagcgagagcct

SEQ ID NO: 17155 - DNA, 201 bp, Homo sapiens
catttgaaggatctgagtaacaattttattttagactttcaatatttacaatttactggaagtcacttttagcaactacttaaactgatgaccaagaaagyctatagatgtcaacctaataatgtgctagggggtacaatgtcttttgaaattattttagggaatagatgagtaaaaatagacaaattgaagaccaaatta

SEQ ID NO: 17156 - DNA, 201 bp, Homo sapiens
acgttgatttacccttagagtctccagaaaggaacacagtcctgcagacaccttgattttggcccagcgagagccttgttggacttctagcctacagaacygtcagataatacatttgggttgctttaaacctctaagtttatggtaattcattatggtggaaaatgaatacagcagagtctttgaagttggacatttttc

SEQ ID NO: 17157 - DNA, 201 bp, Homo sapiens
gtaactgtcaattctgagtttcccaactggatcagttgtgacttttatttctttcgcacctgcctgtctcatcttttttttttttttaattgtatccaaayacagacagcaggtttctgaaaggatctcactctgttgcccaggctggagtgcagtgacacgatatcaactcaaagcaacctctgcctcccaggtgcaggc

SEQ ID NO: 17158 - DNA, 201 bp, Homo sapiens
taaaaagcacgttaataactctcacaagtaattagcaaacagagtccaagggcttgaggaagggattgagtttctgatctctcttgggtggttcctcaacrtgtgtgaccttgaccaagtattgtcctcacttcttccatctgtgaagatgaaagcaactcttaatacttagaatcattgctgaggccttggtgtcagttg

SEQ ID NO: 17159 - DNA, 201 bp, Homo sapiens
ttgtttgtttgtttgtttgttttttgagacggagtcttgctctgttgcccaggctggactgcagtggcacgatctcggctcactgcaagctccgcctcccrggttcacaccattctcctgcctcagcctcccgagtagctgggactctaggtgcccaccaccacgcccggctaattttttgtatttttagtagagacgggg

SEQ ID NO: 17160 - DNA, 201 bp, Homo sapiens
aacccacagcctgtgggccacacgcggcccaggacaacttttaatgcaacacaaaacaaatttataaactttcttaaaacattatgaaatttttttgtgattttttttttttttttgcttatcagcaatcgttagtgttagtgtattgtacgtgtggctcaagacagttctctttttccagtgtggaccagggaagccaaa

SEQ ID NO: 17161 - DNA, 201 bp, Homo sapiens
actaattgatctgataactggggaccacattcttttacaatgattttttattctttgctcagaataaagtttgaaaacctacttaggatattctaaataattttttttttttttttttagatagggtcctactctgttgcccaggctggactgcagtggtgcaaggattctcatgcctcatcctcccaagtagctgggatt

SEQ ID NO: 17162 - DNA, 201 bp, Homo sapiens
tacaaagatgatctcactccttcatttcatcagtcccatgaggcggggatgattatcaacatcttattgatgaagaaacaagctccaagaggtaatgtggycaacgtcttaaacttgaagttgaagagcaagaatctgagccctgttttagatttttaatctctgtgtaaacttcttccttttgttccatcttttctcttt

SEQ ID NO: 17163 - DNA, 201 bp, Homo sapiens
ccatgccgtacccagatccctgatccatagaaattgtgagaaatgtgtgtgtgtgtgtgtgtgtgtgtgtgtgtgtctgtgtgtgtttgagacaaggtttkcccaggctggagtgcagtggtgtgatcatggcttactgcagccttgacctcccaggctcaagcgatcctgctacctcagcctcctgagtagctgtgacta

SEQ ID NO: 17164 - DNA, 201 bp, Homo sapiens
aggctggagtgcagtggtgtgatcatggcttactgcagccttgacctcccaggctcaagcgatcctgctacctcagcctcctgagtagctgtgactacagsctcatcccaccgtacctggctaattaaaactttttttttgtggcaatgggggtctcactatgctccccaggctggtcttgaactcctggactcaagtgat

SEQ ID NO: 17165 - DNA, 201 bp, Homo sapiens
ttgtggcaatgggggtctcactatgctccccaggctggtcttgaactcctggactcaagtgatcctcccgcctttgcatcccaaagtgctgggattatagrtctgagccaccaagcccggcaatgtttgttcttttaagctgcttagctttgagggattttgttacaaagcaatagataactagtacagctgggtaggtct

SEQ ID NO: 17166 - DNA, 201 bp, Homo sapiens
tctgcttcccagagtgctgggattacaggcgtgagccaccgtgcccggcctatggatgcctttcttcccaggaataaccagcacaggagccaggtcattgkcctttgctaataagtgaatataatcattattttttaaatggaaacaactctctcaaataattttcaattgatttttgaaacaacaaacaagcagctttat

SEQ ID NO: 17167 - DNA, 201 bp, Homo sapiens
ggggactagagccatctctgggaggttttcctaggacgtaagctctgttgtttcggagttcagggagtggggcagtgacctgcataaagagcccccagggwgaaggcccagggtcctggcttctccgtgggactgtttcccgggtcacagaaagggagacccaagtgtcagagatgggcagattgaactgtccctgccggt

SEQ ID NO: 17168 - DNA, 201 bp, Homo sapiens
tgtttctatttaaaatcaccttatttactgtctattgttggattgttagtattgaactcatggccaacaatactgtagctcaggtttgaatgaagcttgcytaacacatatactagacaacacttcagcactgtgcttgggaactttttaagcagtgaaatcatcaaaccgaagcacacaaatgtaaaaaacagggcagta

SEQ ID NO: 17169 - DNA, 201 bp, Homo sapiens
atgtggtcatagaattattcagagaaagctaattgaaagcaaaatgcattaaaatgactaggattaagctgcccacggacaccaactgtcttgttttgtcmccattgtaaacacaagtgccccagaagtgcatgtgctgaagttggcctctgttgaatgaatgcatttaaatgtggaagtttttgtattattataggataa

SEQ ID NO: 17170 - DNA, 201 bp, Homo sapiens
gaggcggatgttgctgtgagccgagagcatgccactgtactccagcctgggtgacagagtgagactccgtctcaaaaaaaaaaaaaaaaagactaaaatgrcattacaactgatcccatagaaatacaaaagatcctcagagactattatgaacacttctaggtatacaaactagaaaatctagaggaaatgggtaagttc

SEQ ID NO: 17171 - DNA, 201 bp, Homo sapiens
ttccaaaaaatcaaggaggagggactcctccctcattctacaaacccagcatcatcctgatagcagaatctggcaaagacacaatgaaaaaagaaaactayaggccgatattcctgatgaacacagatgcaaaaatcctcaacaaaatactagcaagctgaatcccaaagcatatccaaaagttaattcactatgatcaag

SEQ ID NO: 17172 - DNA, 201 bp, Homo sapiens
ctgaatggatgaaagctggaagcatttcccttaagacctggaacaagatgaggatgtctagttttgctgcatagtaccggaagtcctagctacagcaatcmggcaagagaaagaaataagaagcatccatataggatgcttttatcattgtttgctcatgatatgatttgatatctagaaagccctaaagactctgccaag

SEQ ID NO: 17173 - DNA, 201 bp, Homo sapiens
aacctatttctaagtctttccttctatcaatgaatgagttaggaaggtagcctcctgaagaaattatttaaaaatcttgatttttctttgggtagataaagaaaagaaaagtagtaaaaaagagtcttaaaattattcaaatcaatgaaattcttcattgtagttatttaaagtccatagacatatagatttcaatgtata

SEQ ID NO: 17174 - DNA, 201 bp, Homo sapiens
aatcaaagtagaaaaatcagtagcatttctatgcatcaatagtgttcaagctgagagccaaatcaagaacacaattccatttacaatagccacaaaaaaamccacaaaatacctaggaatacatctagtcaaggaggggagagatctcttcaaggagagttacaaaacactgctgaaagaaatcatagataacataaacaa

SEQ ID NO: 17175 - DNA, 201 bp, Homo sapiens
atcaaagtagaaaaatcagtagcatttctatgcatcaatagtgttcaagctgagagccaaatcaagaacacaattccatttacaatagccacaaaaaaacmcacaaaatacctaggaatacatctagtcaaggaggggagagatctcttcaaggagagttacaaaacactgctgaaagaaatcatagataacataaacaag

SEQ ID NO: 17176 - DNA, 201 bp, Homo sapiens
ttaatttatacccttttctgtggtgaattatgttaataattagttaaattcttatttagttaaatttagttaaattatttcaagtatattattgtattagmataaagttctgtggggaaaatggaatggaaatatgactttaaggaacattataaaacaagataagcatgtacatttatatcgttaagtgaacagtgatga

SEQ ID NO: 17177 - DNA, 201 bp, Homo sapiens
ggctttaaattggctttaaattacttcagagtaattttagtacatcttaggggtgacagttttcctatgaatgaccgctgaaagtcaggggtaaattaggsttacctgaagcaatttgacttttttttaaacgcttgttcccttctgtgtccattcaaaacctacctgcatttcataaccctagtataatgggaataagtt

SEQ ID NO: 17178 - DNA, 201 bp, Homo sapiens
atatacatttgaacctatatagtcaaaggaccttttttaaaaaatgttaatttatacccttttctgtggtgaattatgttaataattagttaaattcttayttagttaaatttagttaaattatttcaagtatattattgtattagaataaagttctgtggggaaaatggaatggaaatatgactttaaggaacattataa

SEQ ID NO: 17179 - DNA, 201 bp, Homo sapiens
agaccagtcccgcccatttcattgagatgattttccattaaaatttaaatttttaagtttatttattaatatttaaaatatatttgtattgttttgatcarttgtgaactaagtaaaacatagtatggtaattcccaaaataaaacttaaaaatatacatttgaacctatatagtcaaaggaccttttttaaaaaatgtta

SEQ ID NO: 17180 - DNA, 201 bp, Homo sapiens
aaacaaagaacaacattgatattaacctctgtctcattctattgataaatagtattcattcatggagagattaactaattagaaaaatcagaccagtcccrcccatttcattgagatgattttccattaaaatttaaatttttaagtttatttattaatatttaaaatatatttgtattgttttgatcagttgtgaactaa

SEQ ID NO: 17181 - DNA, 201 bp, Homo sapiens
tttgctcagaataaagtttgaaaacctacttaggatattctaaataattttttttttttttttttagatagggtcctactctgttgcccaggctggactgyagtggtgcaaggattctcatgcctcatcctcccaagtagctgggattacaggcacccaccaccactcccggctaatttttgtatttttagtagagatggg

SEQ ID NO: 17182 - DNA, 201 bp, Homo sapiens
ggaccctgtgaactagtactgatattgagaaaactaattgatctgataactggggaccacattcttttacaatgattttttattctttgctcagaataaartttgaaaacctacttaggatattctaaataattttttttttttttttttagatagggtcctactctgttgcccaggctggactgcagtggtgcaaggatt

SEQ ID NO: 17183 - DNA, 201 bp, Homo sapiens
tatatcttcagagaatgcaactgaggcataagctatgatttctatttactgataagtaatttttattttatgggtttgatgattgcatcaaataggtgtakgtgtgtgtgtgtgtgtgtgtgtgtgtgtgtgtgtgtgatggttaagaatgtgagctatattaattaggtcaaatctggctcaaatctagtgtgacctggg

SEQ ID NO: 17184 - DNA, 201 bp, Homo sapiens
aatcccctatatttgcttttctcagactcatctctccataggcacccttatgacttgcagagtttcttgcttattttttctccccacacttgcccttttcrtgttcctacttccatcctttgattcactccttatcttgctatggtggaaaaacccaagcaaagggaccctgtgaactagtactgatattgagaaaactaa

SEQ ID NO: 17185 - DNA, 201 bp, Homo sapiens
gcagttctcctgcctcagcctcctgagttgctgggattacaggcgcccgccaccatgcccagctaatttttgtatttttattagagacggggttttgctaygttggccaagctggtctcaaactcctgacctcaggtgatccgcccaccttggcctcccaaagtgctagaataacaggcatgagccatcatgcctggcccc

SEQ ID NO: 17186 - DNA, 201 bp, Homo sapiens
caaaactaagaaagactttgggaccatacaattattccaaagccactgaagtgtatgtaaatgtgtgggtgtcctggggatgcatctccttcccaagggartacgtggggactgagacagtgtcaacaaaatcaacctccagatcctcaaatcccctatatttgcttttctcagactcatctctccataggcacccttatg

SEQ ID NO: 17187 - DNA, 201 bp, Homo sapiens
ctttattatttaactctaaagttataaaatgccttatttgcatattacattttacagcaatggtataaagcttataaacaaggttctattttttagagaaktgtttaaaacagaggtttctgccagtgagaatatgagccttacctagtatttagccttgagctttgagcaagggattatgttgatagccataaatgaaga

SEQ ID NO: 17188 - DNA, 201 bp, Homo sapiens
atgctaggttggctctagggacacccaacaacattgattgacttattaatcaggatggaagtcaggactatcagctggtcctctgtactgagtgtacataragagatttagggaaaactgaccttaaagaaattaatcttaaaaaggtgtgataccactttgggaggtcaaggagggcggattgcttgaggccaagagttt

SEQ ID NO: 17189 - DNA, 201 bp, Homo sapiens
aattcaacacttgaccaattagacctaatagacttctacagactacttcagccaatagccacagaatatacattcttctcatttgcaaatggaacatactstaagatcaagcacatcttcagccataaagcaagtctcagtaaaataataatttaaaaaaccatactaagcatactctcagatgacagtggaataaaatag

SEQ ID NO: 17190 - DNA, 201 bp, Homo sapiens
caagagatgtgccataagtcacttacttacatggaatagatttaatttcaatacaatttagcatgcatttattgggtgcatgctaggttggctctagggayacccaacaacattgattgacttattaatcaggatggaagtcaggactatcagctggtcctctgtactgagtgtacatagagagatttagggaaaactgac

SEQ ID NO: 17191 - DNA, 201 bp, Homo sapiens
agcagttctcctgcctcagcctcctgagttgctgggattacaggcgcccgccaccatgcccagctaatttttgtatttttattagagacggggttttgctrtgttggccaagctggtctcaaactcctgacctcaggtgatccgcccaccttggcctcccaaagtgctagaataacaggcatgagccatcatgcctggccc

SEQ ID NO: 17192 - DNA, 201 bp, Homo sapiens
aatagccacagaatatacattcttctcatttgcaaatggaacatactctaagatcaagcacatcttcagccataaagcaagtctcagtaaaataataattwaaaaaaccatactaagcatactctcagatgacagtggaataaaatagaaatcaatgccaagaagatctctcaaaactagacaattacatggaaattaaac

SEQ ID NO: 17193 - DNA, 201 bp, Homo sapiens
tttctgactcccaactcttcactctcaagtacagtattgtgtaggctgtactatgcagctaacatattaaccaagtaataagagaagaagccaagagatattatgttggttttctatttctgtcatgaggaacacatgggaacctatttctaagtctttccttctatcaatgaatgagttaggaaggtagcctcctgaaga

SEQ ID NO: 17194 - DNA, 201 bp, Homo sapiens
gggaacctatttctaagtctttccttctatcaatgaatgagttaggaaggtagcctcctgaagaaattatttaaaaatcttgatttttctttgggtagataaagaaaagaaaagtagtaaaaaagagtcttaaaattattcaaatcaatgaaattcttcattgtagttatttaaagtccatagacatatagatttcaatgt

SEQ ID NO: 17195 - DNA, 201 bp, Homo sapiens
ctctccatagatattagtttcttgcaagaatttctgtaggccaagcttgtccaacccacagcctgtgggccacacgcggcccaggacaacttttaatgcarcacaaaacaaatttataaactttcttaaaacattatgaaatttttttgtgattttttttttttttttgcttatcagcaatcgttagtgttagtgtattgt

SEQ ID NO: 17196 - DNA, 201 bp, Homo sapiens
taatggcttttctccatccctaaatgaaccaaaaaatgatagaacagacatctgtggatggagattgctggaagattagtgtgaaggggaaaaaggatcakcaatagcgctgccgttgctgggaagggggtggggagaggctgtcgcagaggaagactaaacagtgacgagttaatgggtgcagcacaccaacatggcaca

SEQ ID NO: 17197 - DNA, 201 bp, Homo sapiens
ggaacctatttctaagtctttccttctatcaatgaatgagttaggaaggtagcctcctgaagaaattatttaaaaatcttgatttttctttgggtagataaagaaaagaaaagtagtaaaaaagagtcttaaaattattcaaatcaatgaaattcttcattgtagttatttaaagtccatagacatatagatttcaatgta

SEQ ID NO: 17198 - DNA, 201 bp, Homo sapiens
gaacctatttctaagtctttccttctatcaatgaatgagttaggaaggtagcctcctgaagaaattatttaaaaatcttgatttttctttgggtagataaagaaaagaaaagtagtaaaaaagagtcttaaaattattcaaatcaatgaaattcttcattgtagttatttaaagtccatagacatatagatttcaatgtat

SEQ ID NO: 17199 - DNA, 201 bp, Homo sapiens
gcataagatagggaggttatctgggtagacctgacctcatcacatgagttctttaaatctgagtctagtggtcagagacagaggcagtccaaggtctgaamccaatcaaccaacaaaacgtcactgaggacagaaaatccgcctccccaaccccagtcgttttgtatttactgggacccttgtctctttttacttctgagt

SEQ ID NO: 17200 - DNA, 201 bp, Homo sapiens
gaattccaccatgacccttactcttgtgtaatctccttgccttcactgtggttggcacttgtgaatatgatgagctattactcttgtcattatgttatgtyatatagcaaaagagattttgcagatataaccaactttccaaatccgttgagcataagatagggaggttatctgggtagacctgacctcatcacatgagtt

SEQ ID NO: 17201 - DNA, 201 bp, Homo sapiens
tcttcaaggagagttacaaaacactgctgaaagaaatcatagataacataaacaagtaacaaaacattctaggcacatgtatcagaagattattagtaaarcagccatactggccaaagtaatgtacagattcagtgctattcctatcaaactatcaacataattttttacagaattagaaaaactaaagttcacatggaa

SEQ ID NO: 17202 - DNA, 201 bp, Homo sapiens
gattcagtgctattcctatcaaactatcaacataattttttacagaattagaaaaactaaagttcacatggaaccaaaaaagagtccaaatagccaaagamatcctaagcaaacgaataaagctggaagcatcacaatactcaatttcaaactaaactgtaaggctatggtaaccaaaacagcatggtacaacttcaaaaa

SEQ ID NO: 17203 - DNA, 201 bp, Homo sapiens
gggttataaaatcttatggaatatgggaggcattaaaccacgtagtttaaaaaaggagaattttctcatgaacaatgtaatggaaagcctgattaatgaaraacttggaatttgggtgggatcttcatttaggaatgtgttttctgaagttttaaaaaatagcaaaaatactatacatgaagcatattcattgagacagga

SEQ ID NO: 17204 - DNA, 201 bp, Homo sapiens
gaagcaatttgacttttttttaaacgcttgttcccttctgtgtccattcaaaacctacctgcatttcataaccctagtataatgggaataagttttttttkttttttttttttgccaaaaccttctggaacatgctgaatatcatggtatgaagaaaatatttagtaaaattgctaagcaaggggtttagagctaacaccc

SEQ ID NO: 17205 - DNA, 201 bp, Homo sapiens
aacttgatggaaagaggaaaaaatcctccagatgatacaaagtagacctttcttctcatgctccatagaggtctttcgggaaaaatttcccatttctactyatgtttggaaaaccttgggtgtgtattttcactgtgtatttaaccttctttcctggcttctagaactgtgctgtccaatatggtagacactggccatgtg

SEQ ID NO: 17206 - DNA, 201 bp, Homo sapiens
aagcaatttgacttttttttaaacgcttgttcccttctgtgtccattcaaaacctacctgcatttcataaccctagtataatgggaataagtttttttttktttttttttttgccaaaaccttctggaacatgctgaatatcatggtatgaagaaaatatttagtaaaattgctaagcaaggggtttagagctaacaccct

SEQ ID NO: 17207 - DNA, 201 bp, Homo sapiens
taacttgttttaattattggctgaaacttgatggaaagaggaaaaaatcctccagatgatacaaagtagacctttcttctcatgctccatagaggtctttygggaaaaatttcccatttctacttatgtttggaaaaccttgggtgtgtattttcactgtgtatttaaccttctttcctggcttctagaactgtgctgtcc

SEQ ID NO: 17208 - DNA, 201 bp, Homo sapiens
aaacagcatgaaatgttggtgtcctgacctaagagaataatgtctaaaatgccaagagaaggatggaaaatatgtaacacctcattaaatatagtgttacyacactgtaattttttttctgtaactctgaatcagagcatccaataaattttacacgggacgaatgtacttctataaaaacaatgttctttcctgttccag

SEQ ID NO: 17209 - DNA, 201 bp, Homo sapiens
actctttgggggaagacaagaatttacacaaggtgttgggatgaaaaatattgctaacttgttttaattattggctgaaacttgatggaaagaggaaaaartcctccagatgatacaaagtagacctttcttctcatgctccatagaggtctttcgggaaaaatttcccatttctacttatgtttggaaaaccttgggtgt

SEQ ID NO: 17210 - DNA, 201 bp, Homo sapiens
agtaacatggagcattattgtaaagactatgttagaaaaaggaagcaagacttccaatgtggtgcctgacatctggtgcttaatgaggttggctttattcwctccctggccttaacctgcaaaaccaggataataatgcttattgcatcccctccccatctgtccagccagcgatcctacagggaatcatccttcccccac

SEQ ID NO: 17211 - DNA, 201 bp, Homo sapiens
attaaaatttaaatttttaagtttatttattaatatttaaaatatatttgtattgttttgatcagttgtgaactaagtaaaacatagtatggtaattcccmaaataaaacttaaaaatatacatttgaacctatatagtcaaaggaccttttttaaaaaatgttaatttatacccttttctgtggtgaattatgttaataa

SEQ ID NO: 17212 - DNA, 201 bp, Homo sapiens
aagcaagccctcaggcttacttgaatgaaacaggtctggtctgaattgattttcttcccaaagaaatcaggcttataaacaagtggtcctatttgaacatmaaatttacctacgcattgcaggttatctaataagtccatgcacaggcatttttaacatccccacaaattaatctattatatgcacttcttttcttctcca

SEQ ID NO: 17213 - DNA, 201 bp, Homo sapiens
tgaatcgctccaatctctgtttccattgtcacatgtattgctataattaaatagcagcagactgcttcagattattatgtgtatgcatacacacacttcaygaaaaacagaagcatttttaaaatgagggatattggccctatttttttaattgggaacagaagaatttatcagtttatttcaagcaagccctcaggctta

SEQ ID NO: 17214 - DNA, 201 bp, Homo sapiens
ggtgatacactcattttcatatctgtattagattatttagggcaatccaaagtcataggtgataattattaaaatggaattttattttagaggacattaawtacttttaatgtaggatgattatgggatgtgtctacatagttaatttgtaaaggcatgtcattttattagggcactgaattagtttcctattgccactgt

SEQ ID NO: 17215 - DNA, 201 bp, Homo sapiens
taggaggaattttggggcttaagcagcaactaaatttggaggttacttgaagaggagaacaacaggctttcgcacctgcccatgttattttggggagaagyagagacagagaaacctagaagattattaaacgattaaagactttccagaaagcattaataaggccacaagtatttgggtgccctttgctttttctcatgc

SEQ ID NO: 17216 - DNA, 201 bp, Homo sapiens
caaacattttctaggccacggtcttggttttgccatttgctcctattaaaacccctcccattcaaggcctagatctcaggcatgaacatctcaagtgcatrcaaagccagcgtaggaggaattttggggcttaagcagcaactaaatttggaggttacttgaagaggagaacaacaggctttcgcacctgcccatgttatt

SEQ ID NO: 17217 - DNA, 201 bp, Homo sapiens
atggtggtgtgcacctgtagtcccagctactcaggaggctgaggcaggggaatcacttgaacccaggaggtagaggttgcagtgggctgagatcatgcctytgcactccagcctgggtgacagagtgagaccctgtctcaaaaaacaaaaacaaaaacaaaaacaaaaaacctgatacatgtagtgaagaagctgatctgt

SEQ ID NO: 17218 - DNA, 201 bp, Homo sapiens
ctagaacttaaactattattaaaaaaaaaaaaccagtggcttgcaaagggtggcaatcaggctaccaaaaggttacatggggcaaaactcctgtgtgtgaraaaaatggggttggggggagtgggtaggcaacttaagtcaaaacattggtgacccagagagaaaaggaagagcaaaatgtaaggtgtgggtggaggaaat

SEQ ID NO: 17219 - DNA, 201 bp, Homo sapiens
gccgtagacatttctgcaagtgaaatagttgggatccagctttgcctgagacagtgctcttccagtccctctgctatcaacaaaaatgcccacgctctttytaggcactgctataggacttggcagaggcttatgtgctttgaggtccctttacctctaagcccattcacaaacattttctaggccacggtcttggttttg

SEQ ID NO: 17220 - DNA, 201 bp, Homo sapiens
gtattgtacgtgtggctcaagacagttctctttttccagtgtggaccagggaagccaaaagattggacacccctgccgtagacatttctgcaagtgaaatmgttgggatccagctttgcctgagacagtgctcttccagtccctctgctatcaacaaaaatgcccacgctctttctaggcactgctataggacttggcaga

SEQ ID NO: 17221 - DNA, 201 bp, Homo sapiens
catgtagggctagaaatagccattgtccagccctgtacctcaaaggcagcaggaagccaagtgtcaccatctgtgatttagcctgcgtcctagaacaaaayggcaggagaggctgggtggctgatgaaagcaagtatcttgtctcaagttcaaagcaacgcttttccgacctgctaggtttctaggagtgacacgtaccac

SEQ ID NO: 17222 - DNA, 201 bp, Homo sapiens
gcttacctgaagcaatttgacttttttttaaacgcttgttcccttctgtgtccattcaaaacctacctgcatttcataaccctagtataatgggaataagtttttttttttttttttttttgccaaaaccttctggaacatgctgaatatcatggtatgaagaaaatatttagtaaaattgctaagcaaggggtttagagc

SEQ ID NO: 17223 - DNA, 201 bp, Homo sapiens
ttctacttctatgcagcatgtagggctagaaatagccattgtccagccctgtacctcaaaggcagcaggaagccaagtgtcaccatctgtgatttagcctrcgtcctagaacaaaacggcaggagaggctgggtggctgatgaaagcaagtatcttgtctcaagttcaaagcaacgcttttccgacctgctaggtttctag

SEQ ID NO: 17224 - DNA, 201 bp, Homo sapiens
cttacctgaagcaatttgacttttttttaaacgcttgttcccttctgtgtccattcaaaacctacctgcatttcataaccctagtataatgggaataagtttttttttttttttttttttgccaaaaccttctggaacatgctgaatatcatggtatgaagaaaatatttagtaaaattgctaagcaaggggtttagagct

SEQ ID NO: 17225 - DNA, 201 bp, Homo sapiens
agcaatttgacttttttttaaacgcttgttcccttctgtgtccattcaaaacctacctgcatttcataaccctagtataatgggaataagttttttttttkttttttttttgccaaaaccttctggaacatgctgaatatcatggtatgaagaaaatatttagtaaaattgctaagcaaggggtttagagctaacacccta

SEQ ID NO: 17226 - DNA, 201 bp, Homo sapiens
tccctggccttaacctgcaaaaccaggataataatgcttattgcatcccctccccatctgtccagccagcgatcctacagggaatcatccttcccccaccttttttttttaacttttattttagtttcaggggtacatgtgcaggtttgttatataagtaaattgtgtgttgccagggtttggtgtaaagattatttcacc

SEQ ID NO: 17227 - DNA, 201 bp, Homo sapiens
ttgtctgcagtgattacctgtctcatgaatgtatcccttttagtttacctcccttcctagtctcactttctccattgccctacctgtgctttctgaggttwtctcccaaataaactacctgcacccagcttctatctcagaatctgtatttgggggacatcaaaaccaagagatgtgccataagtcacttacttacatgga

SEQ ID NO: 17228 - DNA, 201 bp, Homo sapiens
atgcttgttggctgcgtgtgtgtcttcatttgaaaagtgcctgttcatgttctttgcccatgttttaatggggttgtatgttttatgcttattgatttaarctccttatagattctgatgcatagtttgcaaatattttctcccattctgtaggttgtctgtttagtctgttgatagtttcttttgctgtgaagaagctct

SEQ ID NO: 17229 - DNA, 201 bp, Homo sapiens
gcaaatattttctcccattctgtaggttgtctgtttagtctgttgatagtttcttttgctgtgaagaagctcttaaatttaattaggtcacatttgtcaattttttttttttgttgcaatagcttttggcatctttgtcataagatctttgccaggtcctatttccagaatggtacttcctaggttaccatctgggttttt

SEQ ID NO: 17230 - DNA, 201 bp, Homo sapiens
cttttcagtgctattttttaaacaaagaacaacattgatattaacctctgtctcattctattgataaatagtattcattcatggagagattaactaattasaaaaatcagaccagtcccgcccatttcattgagatgattttccattaaaatttaaatttttaagtttatttattaatatttaaaatatatttgtattgtt

SEQ ID NO: 17231 - DNA, 201 bp, Homo sapiens
tttaagtctttattccatcttgagttggtttttgtatatggtaataggcaggggtccagtttcaatcttctgcatatggctagctagttatcccagaaccrtttattaaatagggagtcctttctttgttgcttgtttttgtgactttgttgaagatcagatgcttgtaggtgtgctgcgttatttctcagctctcaattc

SEQ ID NO: 17232 - DNA, 201 bp, Homo sapiens
gactttccagaaagcattaataaggccacaagtatttgggtgccctttgctttttctcatgcattctcaattcagggaaactaaatgagtacactctcagycccaaagcttcagtgttcctggccatgtttaaagcatggtctgggaatggacactgtatgaatagcccctcaccaggagtcacagctccctggagggtgg

SEQ ID NO: 17233 - DNA, 201 bp, Homo sapiens
cctagggtgctctgcagagttcccagacagcttgcaggtggctccagggactgctcacttctcttttctctctagccctatgtcatgaagggactgctcawttctttcttttttttttttttattattatactttaagttttagggtacatgtgcacaatgtgcaggttagctacatatgtatatatgtgccatgctggtg

SEQ ID NO: 17234 - DNA, 201 bp, Homo sapiens
tctcccttcccccaacttttttagcctaagcctctctccaccacttcctccctcattcaggatttatttatgcaattgatgggtatgacacagcatgtgcygtgtatcccatcctctgtcatttcacccatggacaggcttcttatagggagcgtgagtttttcctgctgggatggggtagagggaggcctccaatcctcc

SEQ ID NO: 17235 - DNA, 201 bp, Homo sapiens
gtttttcctgctgggatggggtagagggaggcctccaatcctcccagagcactgcttgacttgtctgtcacggtgggctgcctctgagaagggcccctatmatattcacacacatgtataatctcttcctcttgaatgtggctggacttagtgacttgcttctaacaaacagaatgtggcaaaagtggtgagatatgactt

SEQ ID NO: 17236 - DNA, 201 bp, Homo sapiens
ttttattattatactttaagttttagggtacatgtgcacaatgtgcaggttagctacatatgtatatatgtgccatgctggtgtgcggcacccattaactygtcatttagcattaggtatatctcctaatgctatccctcccccctccccctaccccacaacagttcccggagtgtgatgttccccttcctgtgagcaact

SEQ ID NO: 17237 - DNA, 201 bp, Homo sapiens
attttagtacatcttaggggtgacagttttcctatgaatgaccgctgaaagtcaggggtaaattaggcttacctgaagcaatttgacttttttttaaacgsttgttcccttctgtgtccattcaaaacctacctgcatttcataaccctagtataatgggaataagtttttttttttttttttttttgccaaaaccttctg

SEQ ID NO: 17238 - DNA, 201 bp, Homo sapiens
ggcttgcaaagggtggcaatcaggctaccaaaaggttacatggggcaaaactcctgtgtgtgagaaaaatggggttggggggagtgggtaggcaacttaaktcaaaacattggtgacccagagagaaaaggaagagcaaaatgtaaggtgtgggtggaggaaatacatgttcaggttcaactgtagagaggtccacaagtg

SEQ ID NO: 17239 - DNA, 201 bp, Homo sapiens
ggcagatcacttgaggccaggagttcaagaccactctggccaatatggtgaaaccccatctctactaaaaatacaaaacttacctcggtggggtggttcasacttgtagtcccagctacttggggggccgaggcccaagaatcgcttaaactctggaagcagaggcttcagtgagctgagattgtaccactgcactccagc

SEQ ID NO: 17240 - DNA, 201 bp, Homo sapiens
attctacttctatgcagcatgtagggctagaaatagccattgtccagccctgtacctcaaaggcagcaggaagccaagtgtcaccatctgtgatttagccygcgtcctagaacaaaacggcaggagaggctgggtggctgatgaaagcaagtatcttgtctcaagttcaaagcaacgcttttccgacctgctaggtttcta

SEQ ID NO: 17241 - DNA, 201 bp, Homo sapiens
ctgggcattctacttctatgcagcatgtagggctagaaatagccattgtccagccctgtacctcaaaggcagcaggaagccaagtgtcaccatctgtgatktagcctgcgtcctagaacaaaacggcaggagaggctgggtggctgatgaaagcaagtatcttgtctcaagttcaaagcaacgcttttccgacctgctagg

SEQ ID NO: 17242 - DNA, 201 bp, Homo sapiens
gttaccctcagcacacatcacagtgcctggcacacagtggcactgaaataccatttaataaagaacactaactgtgacagcacacatagaactatacagcmattcaagtaaatatttttcccattctctttaacacaggacatgaaatcttgaagagacgatagtccctgggcattctacttctatgcagcatgtagggct

SEQ ID NO: 17243 - DNA, 201 bp, Homo sapiens
cacatgctgtattatctttgggaattcacactagaccatgtgtgcttctgctttattcatcagttaccctcagcacacatcacagtgcctggcacacagtrgcactgaaataccatttaataaagaacactaactgtgacagcacacatagaactatacagcaattcaagtaaatatttttcccattctctttaacacagg

SEQ ID NO: 17244 - DNA, 201 bp, Homo sapiens
ctgcgtcccagagagggaaattgatagtgatgtccacaacccacagtattctgcctttgtgaatccccttcacatatgcagtccatcctaggagatgctaygtgacctgggacatcccttgatgccagcacatgctgtattatctttgggaattcacactagaccatgtgtgcttctgctttattcatcagttaccctcag

SEQ ID NO: 17245 - DNA, 201 bp, Homo sapiens
ccagtccctttcatgcttacatccactcctcctgcctacagccttctttttttctgggcgagggaagagtatcttagtgaactgcgtcccagagagggaarttgatagtgatgtccacaacccacagtattctgcctttgtgaatccccttcacatatgcagtccatcctaggagatgctatgtgacctgggacatccctt

SEQ ID NO: 17246 - DNA, 201 bp, Homo sapiens
attacttcagagtaattttagtacatcttaggggtgacagttttcctatgaatgaccgctgaaagtcaggggtaaattaggcttacctgaagcaatttgamttttttttaaacgcttgttcccttctgtgtccattcaaaacctacctgcatttcataaccctagtataatgggaataagttttttttttttttttttttt

SEQ ID NO: 17247 - DNA, 201 bp, Homo sapiens
aggtttttcttgttcagacagagtctttccctctgagcagtggagaatctcagatgatttgggtgcacatactggatatatgctggtgatcctttctgtcrtctccttgggaaacattatttacacaagttccttcatccctacctgtggcccccctgccagtccctttcatgcttacatccactcctcctgcctacagcc

SEQ ID NO: 17248 - DNA, 201 bp, Homo sapiens
atggtcttgatctcctgaccttgtgatccacccgcctcagcctcccaaagtgctgggattataggtatgagccaccacgcctggtcattcttaatgttttygtttgggagacgtgatgagtagagcacaagttgaccccagtgaagcttcaatattgcacagtccttattctggaggtacccgggtattaccgacaagcaa

SEQ ID NO: 17249 - DNA, 201 bp, Homo sapiens
ttgagacggagtcttgctctgttgcccaggctggactgcagtggcacgatctcggctcactgcaagctccgcctcccgggttcacaccattctcctgcctyagcctcccgagtagctgggactctaggtgcccaccaccacgcccggctaattttttgtatttttagtagagacggggtttcaccgtgttagccaggatgg

SEQ ID NO: 17250 - DNA, 201 bp, Homo sapiens
tcattcaggatttatttatgcaattgatgggtatgacacagcatgtgctgtgtatcccatcctctgtcatttcacccatggacaggcttcttatagggagsgtgagtttttcctgctgggatggggtagagggaggcctccaatcctcccagagcactgcttgacttgtctgtcacggtgggctgcctctgagaagggccc

SEQ ID NO: 17251 - DNA, 201 bp, Homo sapiens
tcagtgaaatgtagatcaaaaccacaatgagataccatcttgcatcagtcagactggctattaataaaaagtaaaaaaaaaaataacagatgcttgcaagrctgcggagacaagagaatgcttacacactgctggtgggaatgtaaattagttcagctgctgtggaaagtagtttggaaatttctcaaagaactaaaaata

SEQ ID NO: 17252 - DNA, 201 bp, Homo sapiens
gtgtgtattttgtttcctggccaagccattgtttcataaaactttagatttaggggacatctaaggacacagagagaatggggcagcatcattcctgaaaygggatattttcatgggcaagtataaatgtcttcatcagatagctgcttccaacagattctgagtatgggacgtataattattacacagaatatggcactt

SEQ ID NO: 17253 - DNA, 201 bp, Homo sapiens
gaagtgaaagacactgctataataaaatcgattctattttcaactacttaaataaattctttttggacaagtcttttcagtgctattttttaaacaaagarcaacattgatattaacctctgtctcattctattgataaatagtattcattcatggagagattaactaattagaaaaatcagaccagtcccgcccatttca

SEQ ID NO: 17254 - DNA, 201 bp, Homo sapiens
taggagtgacacgtaccacccagggactctggacaagttgccttgcatgtcaccacctctgtgtgggctaccagctactggcaaggttcatggctgcaggyacaggctgtgcagtcctagggtgctctgcagagttcccagacagcttgcaggtggctccagggactgctcacttctcttttctctctagccctatgtcat

SEQ ID NO: 17255 - DNA, 201 bp, Homo sapiens
gggcattctacttctatgcagcatgtagggctagaaatagccattgtccagccctgtacctcaaaggcagcaggaagccaagtgtcaccatctgtgatttwgcctgcgtcctagaacaaaacggcaggagaggctgggtggctgatgaaagcaagtatcttgtctcaagttcaaagcaacgcttttccgacctgctaggtt

SEQ ID NO: 17256 - DNA, 201 bp, Homo sapiens
ccagacatcagccaggaagaaattgaaaaggccaggactcatgggtgaatggactgtggcgcccattgttgccttttttggggactggctttgtggggcaygagtaggtttttctgggataaaagcataagattgtgagtgaagacattaaccttgactcatacctaagcttgctgtgcacaatcattgacagattttgca

SEQ ID NO: 17257 - DNA, 201 bp, Homo sapiens
tgctgcctttggcttggacccatggatagagcactggaacagaagtctggggtttcagcctgtctttatccatagataaaggatgagcagataaaagatgsttagttcctctcatgagcttcttatttcataatacaatgtcagtaacatggagcattattgtaaagactatgttagaaaaaggaagcaagacttccaatg

SEQ ID NO: 17258 - DNA, 201 bp, Homo sapiens
caaaagatgagagcccataaaagaaggcatagaaataagagccagacatcagccaggaagaaattgaaaaggccaggactcatgggtgaatggactgtggygcccattgttgccttttttggggactggctttgtggggcatgagtaggtttttctgggataaaagcataagattgtgagtgaagacattaaccttgactc

SEQ ID NO: 17259 - DNA, 201 bp, Homo sapiens
attctagctccattacatagtatctatgtgaccttgggttactcaagctctataagcttcaagttctttatatgtaaattgagtatcataatataaacagkgtattgtgagaattagcgggttctcattacttactactaatgctcctttcgatttgaaaagatctgctccttccctcttctcccttcccccaactttttt

SEQ ID NO: 17260 - DNA, 201 bp, Homo sapiens
atgaatgacatttgattgaggcccgataaggaccataaatttctcagaaaatataactaggatgttatagagtcgttaaataatccttcaatgtaaccaarccattgtggaacagatgaaatgaatttgtagttgcaactgtctacttctgaatgctcaaagatatacactaacaaaatctttagatgaaaacagaggaga

SEQ ID NO: 17261 - DNA, 201 bp, Homo sapiens
tattcatgctgggcgtggtggctcattcctgtcatcccagcattttaggaggctgatgtgggaggataccttgagcccaggagttcgagaccagcctgggmaacatggtaaaacctctctctacaaaaaatacaaaaattagctgggcatggtggtgcatgcctgtagtcccagctaccagggaggctgaggtgggaggat

SEQ ID NO: 17262 - DNA, 201 bp, Homo sapiens
tagcgggttctcattacttactactaatgctcctttcgatttgaaaagatctgctccttccctcttctcccttcccccaacttttttagcctaagcctctmtccaccacttcctccctcattcaggatttatttatgcaattgatgggtatgacacagcatgtgctgtgtatcccatcctctgtcatttcacccatggaca

SEQ ID NO: 17263 - DNA, 201 bp, Homo sapiens
tcactataaattcttactataaatcctcccaattcagctgtttatttcaaatcagcactgtctaatacaaacacaatgcagtccatataagccatgtaacrttttctagtggccacatttaaaaaaggttaaaaaaagataaaattaatttcaatacttttaatgcctattatgtaaaaatacttcaatatggaatcaata

SEQ ID NO: 17264 - DNA, 201 bp, Homo sapiens
cttatttactgtctattgttggattgttagtattgaactcatggccaacaatactgtagctcaggtttgaatgaagcttgcctaacacatatactagacarcacttcagcactgtgcttgggaactttttaagcagtgaaatcatcaaaccgaagcacacaaatgtaaaaaacagggcagtaaatagacagttaaaaggac

SEQ ID NO: 17265 - DNA, 201 bp, Homo sapiens
agtacctgataggtagtgtttttgattctcatcctcctcctagtctctttccctcaggtaggctccagtgtctgttgttcacttctttgtgtccatgtgtrcacaatgtttagcttccacttataagtgagaacatggtatttggcttttttgttcctgtgctagttcacttaggataatgatctccagctccatccatgt

SEQ ID NO: 17266 - DNA, 201 bp, Homo sapiens
tgttgccagggtttggtgtaaagattatttcaccagccaagtaataagcacagtacctgataggtagtgtttttgattctcatcctcctcctagtctcttkccctcaggtaggctccagtgtctgttgttcacttctttgtgtccatgtgtacacaatgtttagcttccacttataagtgagaacatggtatttggctttt

SEQ ID NO: 17267 - DNA, 201 bp, Homo sapiens
aatttggaggttacttgaagaggagaacaacaggctttcgcacctgcccatgttattttggggagaagcagagacagagaaacctagaagattattaaacrattaaagactttccagaaagcattaataaggccacaagtatttgggtgccctttgctttttctcatgcattctcaattcagggaaactaaatgagtacac

SEQ ID NO: 17268 - DNA, 201 bp, Homo sapiens
aaatttggaggttacttgaagaggagaacaacaggctttcgcacctgcccatgttattttggggagaagcagagacagagaaacctagaagattattaaaygattaaagactttccagaaagcattaataaggccacaagtatttgggtgccctttgctttttctcatgcattctcaattcagggaaactaaatgagtaca

SEQ ID NO: 17269 - DNA, 201 bp, Homo sapiens
ttcagctggagactgttgtggatgcttagctgagaaaaaaagccaatgttatctaagaggaattctgctacaaacagggaaatggaagaccacacaattcrtgtaaacaatattgctgcttattcttaatgtttttgtttgtttgtttgtttgttttttgagacggagtcttgctctgttgcccaggctggactgcagtgg

SEQ ID NO: 17270 - DNA, 201 bp, Homo sapiens
gaaggggaaaaaggatcagcaatagcgctgccgttgctgggaagggggtggggagaggctgtcgcagaggaagactaaacagtgacgagttaatgggtgcmgcacaccaacatggcacatgtatacatatgtaacaaacctgcacattgtgcccatgtaccctagaacttaaactattattaaaaaaaaaaaaccagtggc

SEQ ID NO: 17271 - DNA, 201 bp, Homo sapiens
catgatgagacccacccatttcaatgaggtacttaggcagcacaccgtcacagagctgatcaaagctctggcatgggttcaatcaggattattccatgggycatatcaaagttcctcactgcaccttcacttcatgtaaaaacaattcatttataattgttttacacttcatgtaaaaacaattcattatataaacttctt

SEQ ID NO: 17272 - DNA, 201 bp, Homo sapiens
aaatggggtcagaaatacgcatgtcaatgtacttttgctgctctcgcgaatttctcaaaagggtatctgtgaatacctaatttaggtttttttggtttcaytttaagtacacatgagcttctggaaagggcgatatttatatatttttttcactgtggtttacgatccagtgtaggtatatttcaggatgtcactcacaat

SEQ ID NO: 17273 - DNA, 201 bp, Homo sapiens
atcccaggaagtgcttttgagggagtggggaattatcaagcagatcatggtggtgggcaaccagggatcctttctgctgggacctctcagaggctgtgtakaacatgcctcatagttgtgcaactgaaggcaaagatgctggggagattgtcctctgctatggactcaaagtttgtgtccttccaatattcctgtgttgaa

SEQ ID NO: 17274 - DNA, 201 bp, Homo sapiens
tttcagaaaacacttctttaattagttgtgtttgaaatgtccttactaatccttactataataactgaatggccaatttcatagcctcagtgggaaaaacraaaaaagagaaagacctgtgttcttgatctgtgccaaacaggaaaatactgtggttcagcaatagaaaatgaagagggaggaaatgtttcaggtcatcaa

SEQ ID NO: 17275 - DNA, 201 bp, Homo sapiens
tatatttagttccttctaatgtaattaaacaaaaatatcttaatttcagaaaacacttctttaattagttgtgtttgaaatgtccttactaatccttactrtaataactgaatggccaatttcatagcctcagtgggaaaaacgaaaaaagagaaagacctgtgttcttgatctgtgccaaacaggaaaatactgtggttc

SEQ ID NO: 17276 - DNA, 20 bp, Homo sapiens
gttgtttgcttcatctctgg

SEQ ID NO: 17277 - DNA, 20 bp, Homo sapiens
gttgtttgcttcatctctgc

SEQ ID NO: 17278 - DNA, 18 bp, Homo sapiens
agtgctgggctcaagaac

SEQ ID NO: 17279 - DNA, 22 bp, Homo sapiens
tgatgctaatctgttctctgtg

SEQ ID NO: 17280 - DNA, 24 bp, Homo sapiens
tctgatgctaatctgttctctgta

SEQ ID NO: 17281 - DNA, 23 bp, Homo sapiens
ataacaagaggaaggagatcaga

SEQ ID NO: 17282 - DNA, 24 bp, Homo sapiens
attatttttctgtttgacataggc

SEQ ID NO: 17283 - DNA, 25 bp, Homo sapiens
cattatttttctgtttgacataggt

SEQ ID NO: 17284 - DNA, 22 bp, Homo sapiens
ggccaacacttctcattctagt

SEQ ID NO: 17285 - DNA, 21 bp, Homo sapiens
ccagagtccacagaaagtttc

SEQ ID NO: 17286 - DNA, 21 bp, Homo sapiens
ccagagtccacagaaagtttt

SEQ ID NO: 17287 - DNA, 21 bp, Homo sapiens
gaaaataacgcaagcagtttc

SEQ ID NO: 17288 - DNA, 21 bp, Homo sapiens
gagccacctatgttctctacc

SEQ ID NO: 17289 - DNA, 22 bp, Homo sapiens
ggagccacctatgttctctact

SEQ ID NO: 17290 - DNA, 20 bp, Homo sapiens
tccctctttgctcattcatc

SEQ ID NO: 17291 - DNA, 22 bp, Homo sapiens
cgaatctcatgttcaggaaata

SEQ ID NO: 17292 - DNA, 21 bp, Homo sapiens
gaatctcatgttcaggaaatg

SEQ ID NO: 17293 - DNA, 17 bp, Homo sapiens
gccatggcccataaaac

SEQ ID NO: 17294 - DNA, 15 bp, Homo sapiens
ggagccccaggaaac

SEQ ID NO: 17295 - DNA, 15 bp, Homo sapiens
ggagccccaggaaag

SEQ ID NO: 17296 - DNA, 17 bp, Homo sapiens
agagccctcggttcttg

SEQ ID NO: 17297 - DNA, 25 bp, Homo sapiens
gcaaatcaagtaaaagatctgtttc

SEQ ID NO: 17298 - DNA, 25 bp, Homo sapiens
gcaaatcaagtaaaagatctgttta

SEQ ID NO: 17299 - DNA, 19 bp, Homo sapiens
ctgcagcagctaaatgtca

SEQ ID NO: 17300 - DNA, 19 bp, Homo sapiens
gcccagaaagatgagttca

SEQ ID NO: 17301 - DNA, 19 bp, Homo sapiens
gcccagaaagatgagttcg

SEQ ID NO: 17302 - DNA, 24 bp, Homo sapiens
tgtccctttttcagagacatagat

SEQ ID NO: 17303 - DNA, 20 bp, Homo sapiens
cacagtcaaagaatcaagcg

SEQ ID NO: 17304 - DNA, 21 bp, Homo sapiens
tcacagtcaaagaatcaagca

SEQ ID NO: 17305 - DNA, 24 bp, Homo sapiens
aaattcttaccctgagttcagttc

SEQ ID NO: 17306 - DNA, 13 bp, Homo sapiens
ccggcctccgcag

SEQ ID NO: 17307 - DNA, 13 bp, Homo sapiens
ccggcctccgcaa

SEQ ID NO: 17308 - DNA, 18 bp, Homo sapiens
gagccagcaacgagatct

SEQ ID NO: 17309 - DNA, 20 bp, Homo sapiens
aagaagttcacagctgaagg

SEQ ID NO: 17310 - DNA, 21 bp, Homo sapiens
caagaagttcacagctgaaga

SEQ ID NO: 17311 - DNA, 20 bp, Homo sapiens
cctgctggagagacagagtg

SEQ ID NO: 17312 - DNA, 20 bp, Homo sapiens
ctgctctcagaacctcagtc

SEQ ID NO: 17313 - DNA, 20 bp, Homo sapiens
ctgctctcagaacctcagtt

SEQ ID NO: 17314 - DNA, 21 bp, Homo sapiens
cactgcagggaaatagagaaa

SEQ ID NO: 17315 - DNA, 23 bp, Homo sapiens
aaaactgtatacgtgttttgtcc

SEQ ID NO: 17316 - DNA, 24 bp, Homo sapiens
aaaaactgtatacgtgttttgtca

SEQ ID NO: 17317 - DNA, 24 bp, Homo sapiens
accagcattcaagatactgtttac

SEQ ID NO: 17318 - DNA, 15 bp, Homo sapiens
gcggtgaggggaacc

SEQ ID NO: 17319 - DNA, 15 bp, Homo sapiens
gcggtgaggggaact

SEQ ID NO: 17320 - DNA, 18 bp, Homo sapiens
gctcgcggaaacgtactt

SEQ ID NO: 17321 - DNA, 21 bp, Homo sapiens
tgtgtatatccacggcattat

SEQ ID NO: 17322 - DNA, 21 bp, Homo sapiens
tgtgtatatccacggcattaa

SEQ ID NO: 17323 - DNA, 18 bp, Homo sapiens
tgccctcacccaatattc

SEQ ID NO: 17324 - DNA, 22 bp, Homo sapiens
cacacatatggtggttcataac

SEQ ID NO: 17325 - DNA, 23 bp, Homo sapiens
acacacatatggtggttcataat

SEQ ID NO: 17326 - DNA, 19 bp, Homo sapiens
catgtcccagctcttcttg

SEQ ID NO: 17327 - DNA, 15 bp, Homo sapiens
ctgtcccgtgttccg

SEQ ID NO: 17328 - DNA, 17 bp, Homo sapiens
tactgtcccgtgttcca

SEQ ID NO: 17329 - DNA, 19 bp, Homo sapiens
ctctcccagagccctctag

SEQ ID NO: 17330 - DNA, 18 bp, Homo sapiens
ttcctctcatttccatca

SEQ ID NO: 17331 - DNA, 17 bp, Homo sapiens
tcctctcatttccatcg

SEQ ID NO: 17332 - DNA, 17 bp, Homo sapiens
ggccatgcatgtctctg

SEQ ID NO: 17333 - DNA, 15 bp, Homo sapiens
tgctgggtgtccacg

SEQ ID NO: 17334 - DNA, 16 bp, Homo sapiens
ctgctgggtgtccacc

SEQ ID NO: 17335 - DNA, 20 bp, Homo sapiens
aggagctgaggaagatctca

SEQ ID NO: 17336 - DNA, 25 bp, Homo sapiens
gggaagttctttcttgtatattcag

SEQ ID NO: 17337 - DNA, 25 bp, Homo sapiens
gggaagttctttcttgtatattcaa

SEQ ID NO: 17338 - DNA, 21 bp, Homo sapiens
tgctgtctttgcctcactaat

SEQ ID NO: 17339 - DNA, 21 bp, Homo sapiens
cacaacatgaaagagatggaa

SEQ ID NO: 17340 - DNA, 21 bp, Homo sapiens
cacaacatgaaagagatggag

SEQ ID NO: 17341 - DNA, 24 bp, Homo sapiens
aggaaataagacttgaaggaaatc

SEQ ID NO: 17342 - DNA, 21 bp, Homo sapiens
gtatccaagaaagttcttccg

SEQ ID NO: 17343 - DNA, 21 bp, Homo sapiens
gtatccaagaaagttcttccc

SEQ ID NO: 17344 - DNA, 24 bp, Homo sapiens
gagttatcaaaatgaacctgtctc

SEQ ID NO: 17345 - DNA, 16 bp, Homo sapiens
tggtggtgctgtcaac

SEQ ID NO: 17346 - DNA, 16 bp, Homo sapiens
tggtggtgctgtcaat

SEQ ID NO: 17347 - DNA, 16 bp, Homo sapiens
cccgtggagggtctga

SEQ ID NO: 17348 - DNA, 19 bp, Homo sapiens
tgtgactggtccctctcac

SEQ ID NO: 17349 - DNA, 19 bp, Homo sapiens
tgtgactggtccctctcat

SEQ ID NO: 17350 - DNA, 18 bp, Homo sapiens
caggcctgcttggtacaa

SEQ ID NO: 17351 - DNA, 21 bp, Homo sapiens
gtactcctcttcatccattga

SEQ ID NO: 17352 - DNA, 20 bp, Homo sapiens
tactcctcttcatccattgg

SEQ ID NO: 17353 - DNA, 18 bp, Homo sapiens
tccccctcccacacttac

SEQ ID NO: 17354 - DNA, 20 bp, Homo sapiens
gcccctgattttactcattg

SEQ ID NO: 17355 - DNA, 21 bp, Homo sapiens
ggcccctgattttactcatta

SEQ ID NO: 17356 - DNA, 20 bp, Homo sapiens
gggcagatcacatcaacatc

SEQ ID NO: 17357 - DNA, 17 bp, Homo sapiens
tgcaggggactggagtc

SEQ ID NO: 17358 - DNA, 17 bp, Homo sapiens
tgcaggggactggagtt

SEQ ID NO: 17359 - DNA, 18 bp, Homo sapiens
cccttgcagggcttctac

SEQ ID NO: 17360 - DNA, 18 bp, Homo sapiens
gcacgtgcatgtccttac

SEQ ID NO: 17361 - DNA, 18 bp, Homo sapiens
gcacgtgcatgtccttat

SEQ ID NO: 17362 - DNA, 21 bp, Homo sapiens
ccggaagttgtgaaaactaac

SEQ ID NO: 17363 - DNA, 22 bp, Homo sapiens
tactatgcaatcgttcatcagt

SEQ ID NO: 17364 - DNA, 19 bp, Homo sapiens
tatgcaatcgttcatcagc

SEQ ID NO: 17365 - DNA, 24 bp, Homo sapiens
tgcaatctggacactttattataa

SEQ ID NO: 17366 - DNA, 22 bp, Homo sapiens
ttaaatgtggccactagaaaat

SEQ ID NO: 17367 - DNA, 21 bp, Homo sapiens
taaatgtggccactagaaaac

SEQ ID NO: 17368 - DNA, 21 bp, Homo sapiens
cccaattcagctgtttatttc

SEQ ID NO: 17369 - DNA, 19 bp, Homo sapiens
ccctgcctctgtctgactc

SEQ ID NO: 17370 - DNA, 19 bp, Homo sapiens
ccctgcctctgtctgacta

SEQ ID NO: 17371 - DNA, 18 bp, Homo sapiens
aagacaagcccaggttca

SEQ ID NO: 17372 - DNA, 21 bp, Homo sapiens
caaggcatctctgttaaccaa

SEQ ID NO: 17373 - DNA, 21 bp, Homo sapiens
caaggcatctctgttaaccat

SEQ ID NO: 17374 - DNA, 19 bp, Homo sapiens
ggctccagcctctgtagaa

SEQ ID NO: 17375 - DNA, 18 bp, Homo sapiens
aaccaatgccatctgtcc

SEQ ID NO: 17376 - DNA, 20 bp, Homo sapiens
aaaaccaatgccatctgtct

SEQ ID NO: 17377 - DNA, 21 bp, Homo sapiens
ggaccagaaatggatctcttt
